United States Patent Application Publication US 2025/0171800 A1 - sequence listing, part 8

SEQ ID NO: 160842 - DNA, 22 bp, synthetic construct
  misc_feature 1..22: note = chemically synthesized
  source 1..22: mol_type = other DNA
cacttgctagcagcattatgcc

SEQ ID NO: 160843 - DNA, 22 bp, synthetic construct
  misc_feature 1..22: note = chemically synthesized
  source 1..22: mol_type = other DNA
gctagcagcattatgccaaaga

SEQ ID NO: 160844 - DNA, 22 bp, synthetic construct
  misc_feature 1..22: note = chemically synthesized
  source 1..22: mol_type = other DNA
ctagcagcattatgccaaagat

SEQ ID NO: 160845 - DNA, 22 bp, synthetic construct
  misc_feature 1..22: note = chemically synthesized
  source 1..22: mol_type = other DNA
gcagcattatgccaaagatgct

SEQ ID NO: 160846 - DNA, 22 bp, synthetic construct
  misc_feature 1..22: note = chemically synthesized
  source 1..22: mol_type = other DNA
tgccaaagatgcttggaatatt

SEQ ID NO: 160847 - DNA, 22 bp, synthetic construct
  misc_feature 1..22: note = chemically synthesized
  source 1..22: mol_type = other DNA
ggaatattctggtttaatgtgc

SEQ ID NO: 160848 - DNA, 22 bp, synthetic construct
  misc_feature 1..22: note = chemically synthesized
  source 1..22: mol_type = other DNA
gaatattctggtttaatgtgcc

SEQ ID NO: 160849 - DNA, 22 bp, synthetic construct
  misc_feature 1..22: note = chemically synthesized
  source 1..22: mol_type = other DNA
tggtttaatgtgcctgaaatct

SEQ ID NO: 160850 - DNA, 22 bp, synthetic construct
  misc_feature 1..22: note = chemically synthesized
  source 1..22: mol_type = other DNA
gtttaatgtgcctgaaatctat

SEQ ID NO: 160851 - DNA, 22 bp, synthetic construct
  misc_feature 1..22: note = chemically synthesized
  source 1..22: mol_type = other DNA
aatgtgcctgaaatctattttg

SEQ ID NO: 160852 - DNA, 22 bp, synthetic construct
  misc_feature 1..22: note = chemically synthesized
  source 1..22: mol_type = other DNA
atgtgcctgaaatctattttga

SEQ ID NO: 160853 - DNA, 22 bp, synthetic construct
  misc_feature 1..22: note = chemically synthesized
  source 1..22: mol_type = other DNA
aaatctattttgattcctgctt

SEQ ID NO: 160854 - DNA, 22 bp, synthetic construct
  misc_feature 1..22: note = chemically synthesized
  source 1..22: mol_type = other DNA
ttttgattcctgcttgcttcaa

SEQ ID NO: 160855 - DNA, 22 bp, synthetic construct
  misc_feature 1..22: note = chemically synthesized
  source 1..22: mol_type = other DNA
tgattcctgcttgcttcaaatg

SEQ ID NO: 160856 - DNA, 22 bp, synthetic construct
  misc_feature 1..22: note = chemically synthesized
  source 1..22: mol_type = other DNA
gattcctgcttgcttcaaatgt

SEQ ID NO: 160857 - DNA, 22 bp, synthetic construct
  misc_feature 1..22: note = chemically synthesized
  source 1..22: mol_type = other DNA
attcctgcttgcttcaaatgtg

SEQ ID NO: 160858 - DNA, 22 bp, synthetic construct
  misc_feature 1..22: note = chemically synthesized
  source 1..22: mol_type = other DNA
ctgcttgcttcaaatgtggttc

SEQ ID NO: 160859 - DNA, 22 bp, synthetic construct
  misc_feature 1..22: note = chemically synthesized
  source 1..22: mol_type = other DNA
cttgcttcaaatgtggttcatc

SEQ ID NO: 160860 - DNA, 22 bp, synthetic construct
  misc_feature 1..22: note = chemically synthesized
  source 1..22: mol_type = other DNA
gcttcaaatgtggttcatccac

SEQ ID NO: 160861 - DNA, 22 bp, synthetic construct
  misc_feature 1..22: note = chemically synthesized
  source 1..22: mol_type = other DNA
cttcaaatgtggttcatccaca

SEQ ID NO: 160862 - DNA, 22 bp, synthetic construct
  misc_feature 1..22: note = chemically synthesized
  source 1..22: mol_type = other DNA
caaatgtggttcatccacacat

SEQ ID NO: 160863 - DNA, 22 bp, synthetic construct
  misc_feature 1..22: note = chemically synthesized
  source 1..22: mol_type = other DNA
aaatgtggttcatccacacatt

SEQ ID NO: 160864 - DNA, 22 bp, synthetic construct
  misc_feature 1..22: note = chemically synthesized
  source 1..22: mol_type = other DNA
atccacacattgcagggtatag

SEQ ID NO: 160865 - DNA, 22 bp, synthetic construct
  misc_feature 1..22: note = chemically synthesized
  source 1..22: mol_type = other DNA
cagggtatagagtcaggcatcc

SEQ ID NO: 160866 - DNA, 22 bp, synthetic construct
  misc_feature 1..22: note = chemically synthesized
  source 1..22: mol_type = other DNA
gtggccatggccctggaccgtt

SEQ ID NO: 160867 - DNA, 22 bp, synthetic construct
  misc_feature 1..22: note = chemically synthesized
  source 1..22: mol_type = other DNA
tggccatggccctggaccgtta

SEQ ID NO: 160868 - DNA, 22 bp, synthetic construct
  misc_feature 1..22: note = chemically synthesized
  source 1..22: mol_type = other DNA
gaccgttatgtggccatctgtt

SEQ ID NO: 160869 - DNA, 22 bp, synthetic construct
  misc_feature 1..22: note = chemically synthesized
  source 1..22: mol_type = other DNA
tgtggccatctgttatccacta

SEQ ID NO: 160870 - DNA, 22 bp, synthetic construct
  misc_feature 1..22: note = chemically synthesized
  source 1..22: mol_type = other DNA
ttatccactaagacatgccaac

SEQ ID NO: 160871 - DNA, 22 bp, synthetic construct
  misc_feature 1..22: note = chemically synthesized
  source 1..22: mol_type = other DNA
tccactaagacatgccaacatc

SEQ ID NO: 160872 - DNA, 22 bp, synthetic construct
  misc_feature 1..22: note = chemically synthesized
  source 1..22: mol_type = other DNA
agacatgccaacatcttcaccc

SEQ ID NO: 160873 - DNA, 22 bp, synthetic construct
  misc_feature 1..22: note = chemically synthesized
  source 1..22: mol_type = other DNA
cacccaccagcttgtcattcag

SEQ ID NO: 160874 - DNA, 22 bp, synthetic construct
  misc_feature 1..22: note = chemically synthesized
  source 1..22: mol_type = other DNA
acccaccagcttgtcattcaga

SEQ ID NO: 160875 - DNA, 22 bp, synthetic construct
  misc_feature 1..22: note = chemically synthesized
  source 1..22: mol_type = other DNA
gtcattcagataggaactatgg

SEQ ID NO: 160876 - DNA, 22 bp, synthetic construct
  misc_feature 1..22: note = chemically synthesized
  source 1..22: mol_type = other DNA
tcattcagataggaactatggt

SEQ ID NO: 160877 - DNA, 22 bp, synthetic construct
  misc_feature 1..22: note = chemically synthesized
  source 1..22: mol_type = other DNA
agataggaactatggtcgtact

SEQ ID NO: 160878 - DNA, 22 bp, synthetic construct
  misc_feature 1..22: note = chemically synthesized
  source 1..22: mol_type = other DNA
tggtcgtactcagggctgctat

SEQ ID NO: 160879 - DNA, 22 bp, synthetic construct
  misc_feature 1..22: note = chemically synthesized
  source 1..22: mol_type = other DNA
agggctgctattcttgtagccc

SEQ ID NO: 160880 - DNA, 22 bp, synthetic construct
  misc_feature 1..22: note = chemically synthesized
  source 1..22: mol_type = other DNA
ctattcttgtagccccatgcct

SEQ ID NO: 160881 - DNA, 22 bp, synthetic construct
  misc_feature 1..22: note = chemically synthesized
  source 1..22: mol_type = other DNA
ttcttgtagccccatgcctagt

SEQ ID NO: 160882 - DNA, 22 bp, synthetic construct
  misc_feature 1..22: note = chemically synthesized
  source 1..22: mol_type = other DNA
ttgtagccccatgcctagtact

SEQ ID NO: 160883 - DNA, 22 bp, synthetic construct
  misc_feature 1..22: note = chemically synthesized
  source 1..22: mol_type = other DNA
gtagccccatgcctagtactga

SEQ ID NO: 160884 - DNA, 22 bp, synthetic construct
  misc_feature 1..22: note = chemically synthesized
  source 1..22: mol_type = other DNA
tagccccatgcctagtactgat

SEQ ID NO: 160885 - DNA, 22 bp, synthetic construct
  misc_feature 1..22: note = chemically synthesized
  source 1..22: mol_type = other DNA
gtactgataaagtgccggtttc

SEQ ID NO: 160886 - DNA, 22 bp, synthetic construct
  misc_feature 1..22: note = chemically synthesized
  source 1..22: mol_type = other DNA
ataaagtgccggtttcaatttt

SEQ ID NO: 160887 - DNA, 22 bp, synthetic construct
  misc_feature 1..22: note = chemically synthesized
  source 1..22: mol_type = other DNA
caattttatcacacaacagtca

SEQ ID NO: 160888 - DNA, 22 bp, synthetic construct
  misc_feature 1..22: note = chemically synthesized
  source 1..22: mol_type = other DNA
aattttatcacacaacagtcat

SEQ ID NO: 160889 - DNA, 22 bp, synthetic construct
  misc_feature 1..22: note = chemically synthesized
  source 1..22: mol_type = other DNA
tatcacacaacagtcatctccc

SEQ ID NO: 160890 - DNA, 22 bp, synthetic construct
  misc_feature 1..22: note = chemically synthesized
  source 1..22: mol_type = other DNA
atcacacaacagtcatctccca

SEQ ID NO: 160891 - DNA, 22 bp, synthetic construct
  misc_feature 1..22: note = chemically synthesized
  source 1..22: mol_type = other DNA
tcacacaacagtcatctcccac

SEQ ID NO: 160892 - DNA, 22 bp, synthetic construct
  misc_feature 1..22: note = chemically synthesized
  source 1..22: mol_type = other DNA
ccactcctactgtgagcatatg

SEQ ID NO: 160893 - DNA, 22 bp, synthetic construct
  misc_feature 1..22: note = chemically synthesized
  source 1..22: mol_type = other DNA
ctactgtgagcatatggccatt

SEQ ID NO: 160894 - DNA, 22 bp, synthetic construct
  misc_feature 1..22: note = chemically synthesized
  source 1..22: mol_type = other DNA
ctgtgagcatatggccattgtg

SEQ ID NO: 160895 - DNA, 22 bp, synthetic construct
  misc_feature 1..22: note = chemically synthesized
  source 1..22: mol_type = other DNA
tgagcatatggccattgtgaaa

SEQ ID NO: 160896 - DNA, 22 bp, synthetic construct
  misc_feature 1..22: note = chemically synthesized
  source 1..22: mol_type = other DNA
tgaaactagcagcagcaaatgt

SEQ ID NO: 160897 - DNA, 22 bp, synthetic construct
  misc_feature 1..22: note = chemically synthesized
  source 1..22: mol_type = other DNA
gcagcagcaaatgttcaagtca

SEQ ID NO: 160898 - DNA, 22 bp, synthetic construct
  misc_feature 1..22: note = chemically synthesized
  source 1..22: mol_type = other DNA
aagtcaacaaaatctatggttt

SEQ ID NO: 160899 - DNA, 22 bp, synthetic construct
  misc_feature 1..22: note = chemically synthesized
  source 1..22: mol_type = other DNA
tggtttgtttgtggccttcact

SEQ ID NO: 160900 - DNA, 22 bp, synthetic construct
  misc_feature 1..22: note = chemically synthesized
  source 1..22: mol_type = other DNA
gtttgtggccttcactgtagca

SEQ ID NO: 160901 - DNA, 22 bp, synthetic construct
  misc_feature 1..22: note = chemically synthesized
  source 1..22: mol_type = other DNA
tttgtggccttcactgtagcag

SEQ ID NO: 160902 - DNA, 22 bp, synthetic construct
  misc_feature 1..22: note = chemically synthesized
  source 1..22: mol_type = other DNA
gtggccttcactgtagcaggat

SEQ ID NO: 160903 - DNA, 22 bp, synthetic construct
  misc_feature 1..22: note = chemically synthesized
  source 1..22: mol_type = other DNA
tggccttcactgtagcaggatt

SEQ ID NO: 160904 - DNA, 22 bp, synthetic construct
  misc_feature 1..22: note = chemically synthesized
  source 1..22: mol_type = other DNA
cactgtagcaggatttgacctc

SEQ ID NO: 160905 - DNA, 22 bp, synthetic construct
  misc_feature 1..22: note = chemically synthesized
  source 1..22: mol_type = other DNA
actgtagcaggatttgacctca

SEQ ID NO: 160906 - DNA, 22 bp, synthetic construct
  misc_feature 1..22: note = chemically synthesized
  source 1..22: mol_type = other DNA
tagcaggatttgacctcacatt

SEQ ID NO: 160907 - DNA, 22 bp, synthetic construct
  misc_feature 1..22: note = chemically synthesized
  source 1..22: mol_type = other DNA
gacctcacattcatcacattgt

SEQ ID NO: 160908 - DNA, 22 bp, synthetic construct
  misc_feature 1..22: note = chemically synthesized
  source 1..22: mol_type = other DNA
acctcacattcatcacattgtc

SEQ ID NO: 160909 - DNA, 22 bp, synthetic construct
  misc_feature 1..22: note = chemically synthesized
  source 1..22: mol_type = other DNA
acattcatcacattgtcctaca

SEQ ID NO: 160910 - DNA, 22 bp, synthetic construct
  misc_feature 1..22: note = chemically synthesized
  source 1..22: mol_type = other DNA
atcacattgtcctacatccaga

SEQ ID NO: 160911 - DNA, 22 bp, synthetic construct
  misc_feature 1..22: note = chemically synthesized
  source 1..22: mol_type = other DNA
tcctacatccagatatttatca

SEQ ID NO: 160912 - DNA, 22 bp, synthetic construct
  misc_feature 1..22: note = chemically synthesized
  source 1..22: mol_type = other DNA
catccagatatttatcacagtt

SEQ ID NO: 160913 - DNA, 22 bp, synthetic construct
  misc_feature 1..22: note = chemically synthesized
  source 1..22: mol_type = other DNA
atcacagtttttcgtttgcccc

SEQ ID NO: 160914 - DNA, 22 bp, synthetic construct
  misc_feature 1..22: note = chemically synthesized
  source 1..22: mol_type = other DNA
tcacagtttttcgtttgcccca

SEQ ID NO: 160915 - DNA, 22 bp, synthetic construct
  misc_feature 1..22: note = chemically synthesized
  source 1..22: mol_type = other DNA
ttcgtttgccccagaaggaggc

SEQ ID NO: 160916 - DNA, 22 bp, synthetic construct
  misc_feature 1..22: note = chemically synthesized
  source 1..22: mol_type = other DNA
tcgtttgccccagaaggaggct

SEQ ID NO: 160917 - DNA, 22 bp, synthetic construct
  misc_feature 1..22: note = chemically synthesized
  source 1..22: mol_type = other DNA
cgtttgccccagaaggaggcta

SEQ ID NO: 160918 - DNA, 22 bp, synthetic construct
  misc_feature 1..22: note = chemically synthesized
  source 1..22: mol_type = other DNA
gtttgccccagaaggaggctag

SEQ ID NO: 160919 - DNA, 22 bp, synthetic construct
  misc_feature 1..22: note = chemically synthesized
  source 1..22: mol_type = other DNA
gccccagaaggaggctaggttt

SEQ ID NO: 160920 - DNA, 22 bp, synthetic construct
  misc_feature 1..22: note = chemically synthesized
  source 1..22: mol_type = other DNA
ccccagaaggaggctaggttta

SEQ ID NO: 160921 - DNA, 22 bp, synthetic construct
  misc_feature 1..22: note = chemically synthesized
  source 1..22: mol_type = other DNA
ggtttaaagcattcaatacctg

SEQ ID NO: 160922 - DNA, 22 bp, synthetic construct
  misc_feature 1..22: note = chemically synthesized
  source 1..22: mol_type = other DNA
aaagcattcaatacctgcattg

SEQ ID NO: 160923 - DNA, 22 bp, synthetic construct
  misc_feature 1..22: note = chemically synthesized
  source 1..22: mol_type = other DNA
aagcattcaatacctgcattgc

SEQ ID NO: 160924 - DNA, 22 bp, synthetic construct
  misc_feature 1..22: note = chemically synthesized
  source 1..22: mol_type = other DNA
aatacctgcattgctcacatct

SEQ ID NO: 160925 - DNA, 22 bp, synthetic construct
  misc_feature 1..22: note = chemically synthesized
  source 1..22: mol_type = other DNA
cattgctcacatctgtgtcttc

SEQ ID NO: 160926 - DNA, 22 bp, synthetic construct
  misc_feature 1..22: note = chemically synthesized
  source 1..22: mol_type = other DNA
ctcacatctgtgtcttcctcca

SEQ ID NO: 160927 - DNA, 22 bp, synthetic construct
  misc_feature 1..22: note = chemically synthesized
  source 1..22: mol_type = other DNA
acatctgtgtcttcctccagtt

SEQ ID NO: 160928 - DNA, 22 bp, synthetic construct
  misc_feature 1..22: note = chemically synthesized
  source 1..22: mol_type = other DNA
tgtcttcctccagttctacctc

SEQ ID NO: 160929 - DNA, 22 bp, synthetic construct
  misc_feature 1..22: note = chemically synthesized
  source 1..22: mol_type = other DNA
cctccagttctacctccttgcc

SEQ ID NO: 160930 - DNA, 22 bp, synthetic construct
  misc_feature 1..22: note = chemically synthesized
  source 1..22: mol_type = other DNA
ctccagttctacctccttgcct

SEQ ID NO: 160931 - DNA, 22 bp, synthetic construct
  misc_feature 1..22: note = chemically synthesized
  source 1..22: mol_type = other DNA
cagttctacctccttgccttct

SEQ ID NO: 160932 - DNA, 22 bp, synthetic construct
  misc_feature 1..22: note = chemically synthesized
  source 1..22: mol_type = other DNA
tacctccttgccttcttctcct

SEQ ID NO: 160933 - DNA, 22 bp, synthetic construct
  misc_feature 1..22: note = chemically synthesized
  source 1..22: mol_type = other DNA
cctccttgccttcttctccttc

SEQ ID NO: 160934 - DNA, 22 bp, synthetic construct
  misc_feature 1..22: note = chemically synthesized
  source 1..22: mol_type = other DNA
cttgccttcttctccttcttca

SEQ ID NO: 160935 - DNA, 22 bp, synthetic construct
  misc_feature 1..22: note = chemically synthesized
  source 1..22: mol_type = other DNA
gccttcttctccttcttcacac

SEQ ID NO: 160936 - DNA, 22 bp, synthetic construct
  misc_feature 1..22: note = chemically synthesized
  source 1..22: mol_type = other DNA
ccttcttctccttcttcacaca

SEQ ID NO: 160937 - DNA, 22 bp, synthetic construct
  misc_feature 1..22: note = chemically synthesized
  source 1..22: mol_type = other DNA
cttctccttcttcacacatagg

SEQ ID NO: 160938 - DNA, 22 bp, synthetic construct
  misc_feature 1..22: note = chemically synthesized
  source 1..22: mol_type = other DNA
ttctccttcttcacacataggt

SEQ ID NO: 160939 - DNA, 22 bp, synthetic construct
  misc_feature 1..22: note = chemically synthesized
  source 1..22: mol_type = other DNA
ctccttcttcacacataggttt

SEQ ID NO: 160940 - DNA, 22 bp, synthetic construct
  misc_feature 1..22: note = chemically synthesized
  source 1..22: mol_type = other DNA
tccttcttcacacataggtttg

SEQ ID NO: 160941 - DNA, 22 bp, synthetic construct
  misc_feature 1..22: note = chemically synthesized
  source 1..22: mol_type = other DNA
cttcttcacacataggtttggg

SEQ ID NO: 160942 - DNA, 22 bp, synthetic construct
  misc_feature 1..22: note = chemically synthesized
  source 1..22: mol_type = other DNA
cttcacacataggtttgggtct

SEQ ID NO: 160943 - DNA, 22 bp, synthetic construct
  misc_feature 1..22: note = chemically synthesized
  source 1..22: mol_type = other DNA
ttcacacataggtttgggtctc

SEQ ID NO: 160944 - DNA, 22 bp, synthetic construct
  misc_feature 1..22: note = chemically synthesized
  source 1..22: mol_type = other DNA
cacacataggtttgggtctcac

SEQ ID NO: 160945 - DNA, 22 bp, synthetic construct
  misc_feature 1..22: note = chemically synthesized
  source 1..22: mol_type = other DNA
acacataggtttgggtctcaca

SEQ ID NO: 160946 - DNA, 22 bp, synthetic construct
  misc_feature 1..22: note = chemically synthesized
  source 1..22: mol_type = other DNA
gggtctcacatctccccttata

SEQ ID NO: 160947 - DNA, 22 bp, synthetic construct
  misc_feature 1..22: note = chemically synthesized
  source 1..22: mol_type = other DNA
ggtctcacatctccccttatat

SEQ ID NO: 160948 - DNA, 22 bp, synthetic construct
  misc_feature 1..22: note = chemically synthesized
  source 1..22: mol_type = other DNA
acatctccccttatatccatat

SEQ ID NO: 160949 - DNA, 22 bp, synthetic construct
  misc_feature 1..22: note = chemically synthesized
  source 1..22: mol_type = other DNA
cccttatatccatattctcttt

SEQ ID NO: 160950 - DNA, 22 bp, synthetic construct
  misc_feature 1..22: note = chemically synthesized
  source 1..22: mol_type = other DNA
atatccatattctcttttctag

SEQ ID NO: 160951 - DNA, 22 bp, synthetic construct
  misc_feature 1..22: note = chemically synthesized
  source 1..22: mol_type = other DNA
tatccatattctcttttctagc

SEQ ID NO: 160952 - DNA, 22 bp, synthetic construct
  misc_feature 1..22: note = chemically synthesized
  source 1..22: mol_type = other DNA
tcttttctagcatttacttgct

SEQ ID NO: 160953 - DNA, 22 bp, synthetic construct
  misc_feature 1..22: note = chemically synthesized
  source 1..22: mol_type = other DNA
ttttctagcatttacttgctgg

SEQ ID NO: 160954 - DNA, 22 bp, synthetic construct
  misc_feature 1..22: note = chemically synthesized
  source 1..22: mol_type = other DNA
ttctagcatttacttgctggtc

SEQ ID NO: 160955 - DNA, 22 bp, synthetic construct
  misc_feature 1..22: note = chemically synthesized
  source 1..22: mol_type = other DNA
tctagcatttacttgctggtcc

SEQ ID NO: 160956 - DNA, 22 bp, synthetic construct
  misc_feature 1..22: note = chemically synthesized
  source 1..22: mol_type = other DNA
ctagcatttacttgctggtccc

SEQ ID NO: 160957 - DNA, 22 bp, synthetic construct
  misc_feature 1..22: note = chemically synthesized
  source 1..22: mol_type = other DNA
tagcatttacttgctggtccct

SEQ ID NO: 160958 - DNA, 22 bp, synthetic construct
  misc_feature 1..22: note = chemically synthesized
  source 1..22: mol_type = other DNA
gcatttacttgctggtccctcc

SEQ ID NO: 160959 - DNA, 22 bp, synthetic construct
  misc_feature 1..22: note = chemically synthesized
  source 1..22: mol_type = other DNA
acttgctggtccctccatttct

SEQ ID NO: 160960 - DNA, 22 bp, synthetic construct
  misc_feature 1..22: note = chemically synthesized
  source 1..22: mol_type = other DNA
cttgctggtccctccatttctc

SEQ ID NO: 160961 - DNA, 22 bp, synthetic construct
  misc_feature 1..22: note = chemically synthesized
  source 1..22: mol_type = other DNA
gctggtccctccatttctcaat

SEQ ID NO: 160962 - DNA, 22 bp, synthetic construct
  misc_feature 1..22: note = chemically synthesized
  source 1..22: mol_type = other DNA
ctggtccctccatttctcaatc

SEQ ID NO: 160963 - DNA, 22 bp, synthetic construct
  misc_feature 1..22: note = chemically synthesized
  source 1..22: mol_type = other DNA
gtccctccatttctcaatccac

SEQ ID NO: 160964 - DNA, 22 bp, synthetic construct
  misc_feature 1..22: note = chemically synthesized
  source 1..22: mol_type = other DNA
catttctcaatccacttgtcta

SEQ ID NO: 160965 - DNA, 22 bp, synthetic construct
  misc_feature 1..22: note = chemically synthesized
  source 1..22: mol_type = other DNA
ctcaatccacttgtctatggtg

SEQ ID NO: 160966 - DNA, 22 bp, synthetic construct
  misc_feature 1..22: note = chemically synthesized
  source 1..22: mol_type = other DNA
tcaatccacttgtctatggtgc

SEQ ID NO: 160967 - DNA, 22 bp, synthetic construct
  misc_feature 1..22: note = chemically synthesized
  source 1..22: mol_type = other DNA
aatccacttgtctatggtgcaa

SEQ ID NO: 160968 - DNA, 22 bp, synthetic construct
  misc_feature 1..22: note = chemically synthesized
  source 1..22: mol_type = other DNA
gtctatggtgcaaagaccacac

SEQ ID NO: 160969 - DNA, 22 bp, synthetic construct
  misc_feature 1..22: note = chemically synthesized
  source 1..22: mol_type = other DNA
tctatggtgcaaagaccacaca

SEQ ID NO: 160970 - DNA, 22 bp, synthetic construct
  misc_feature 1..22: note = chemically synthesized
  source 1..22: mol_type = other DNA
tggtgcaaagaccacacagatt

SEQ ID NO: 160971 - DNA, 22 bp, synthetic construct
  misc_feature 1..22: note = chemically synthesized
  source 1..22: mol_type = other DNA
gcattcatgtggtaaaaatgtt

SEQ ID NO: 160972 - DNA, 22 bp, synthetic construct
  misc_feature 1..22: note = chemically synthesized
  source 1..22: mol_type = other DNA
atgtggtaaaaatgttctgttc

SEQ ID NO: 160973 - DNA, 22 bp, synthetic construct
  misc_feature 1..22: note = chemically synthesized
  source 1..22: mol_type = other DNA
tgttcataaaatccaccttaat

SEQ ID NO: 160974 - DNA, 22 bp, synthetic construct
  misc_feature 1..22: note = chemically synthesized
  source 1..22: mol_type = other DNA
ttcataaaatccaccttaatta

SEQ ID NO: 160975 - DNA, 22 bp, synthetic construct
  misc_feature 1..22: note = chemically synthesized
  source 1..22: mol_type = other DNA
ataaaatccaccttaattaatg

SEQ ID NO: 160976 - DNA, 22 bp, synthetic construct
  misc_feature 1..22: note = chemically synthesized
  source 1..22: mol_type = other DNA
aattaatgcctacatgcttttt

SEQ ID NO: 160977 - DNA, 22 bp, synthetic construct
  misc_feature 1..22: note = chemically synthesized
  source 1..22: mol_type = other DNA
attaatgcctacatgctttttt

SEQ ID NO: 160978 - DNA, 22 bp, synthetic construct
  misc_feature 1..22: note = chemically synthesized
  source 1..22: mol_type = other DNA
atgcctacatgcttttttcttt

SEQ ID NO: 160979 - DNA, 22 bp, synthetic construct
  misc_feature 1..22: note = chemically synthesized
  source 1..22: mol_type = other DNA
catgcttttttcttttgcagta

SEQ ID NO: 160980 - DNA, 22 bp, synthetic construct
  misc_feature 1..22: note = chemically synthesized
  source 1..22: mol_type = other DNA
ttttcttttgcagtagtaacca

SEQ ID NO: 160981 - DNA, 22 bp, synthetic construct
  misc_feature 1..22: note = chemically synthesized
  source 1..22: mol_type = other DNA
tttcttttgcagtagtaaccat

SEQ ID NO: 160982 - DNA, 22 bp, synthetic construct
  misc_feature 1..22: note = chemically synthesized
  source 1..22: mol_type = other DNA
ttcttttgcagtagtaaccata

SEQ ID NO: 160983 - DNA, 22 bp, synthetic construct
  misc_feature 1..22: note = chemically synthesized
  source 1..22: mol_type = other DNA
tcttttgcagtagtaaccatat

SEQ ID NO: 160984 - DNA, 22 bp, synthetic construct
  misc_feature 1..22: note = chemically synthesized
  source 1..22: mol_type = other DNA
cttttgcagtagtaaccatatc

SEQ ID NO: 160985 - DNA, 22 bp, synthetic construct
  misc_feature 1..22: note = chemically synthesized
  source 1..22: mol_type = other DNA
ttttgcagtagtaaccatatca

SEQ ID NO: 160986 - DNA, 22 bp, synthetic construct
  misc_feature 1..22: note = chemically synthesized
  source 1..22: mol_type = other DNA
ttgcagtagtaaccatatcaaa

SEQ ID NO: 160987 - DNA, 22 bp, synthetic construct
  misc_feature 1..22: note = chemically synthesized
  source 1..22: mol_type = other DNA
tgcagtagtaaccatatcaaaa

SEQ ID NO: 160988 - DNA, 22 bp, synthetic construct
  misc_feature 1..22: note = chemically synthesized
  source 1..22: mol_type = other DNA
gcagtagtaaccatatcaaaac

SEQ ID NO: 160989 - DNA, 22 bp, synthetic construct
  misc_feature 1..22: note = chemically synthesized
  source 1..22: mol_type = other DNA
cagtagtaaccatatcaaaaca

SEQ ID NO: 160990 - DNA, 22 bp, synthetic construct
  misc_feature 1..22: note = chemically synthesized
  source 1..22: mol_type = other DNA
tttgagatgctgggtttgtgaa

SEQ ID NO: 160991 - DNA, 22 bp, synthetic construct
  misc_feature 1..22: note = chemically synthesized
  source 1..22: mol_type = other DNA
gagatgctgggtttgtgaaatc

SEQ ID NO: 160992 - DNA, 22 bp, synthetic construct
  misc_feature 1..22: note = chemically synthesized
  source 1..22: mol_type = other DNA
agatgctgggtttgtgaaatct

SEQ ID NO: 160993 - DNA, 22 bp, synthetic construct
  misc_feature 1..22: note = chemically synthesized
  source 1..22: mol_type = other DNA
ggtttgtgaaatctgccagcac

SEQ ID NO: 160994 - DNA, 22 bp, synthetic construct
  misc_feature 1..22: note = chemically synthesized
  source 1..22: mol_type = other DNA
gtgaaatctgccagcacaatag

SEQ ID NO: 160995 - DNA, 22 bp, synthetic construct
  misc_feature 1..22: note = chemically synthesized
  source 1..22: mol_type = other DNA
tgaaatctgccagcacaatagc

SEQ ID NO: 160996 - DNA, 22 bp, synthetic construct
  misc_feature 1..22: note = chemically synthesized
  source 1..22: mol_type = other DNA
ccagcacaatagctggttttag

SEQ ID NO: 160997 - DNA, 22 bp, synthetic construct
  misc_feature 1..22: note = chemically synthesized
  source 1..22: mol_type = other DNA
gttttagatcatcatggctcat

SEQ ID NO: 160998 - DNA, 22 bp, synthetic construct
  misc_feature 1..22: note = chemically synthesized
  source 1..22: mol_type = other DNA
tagatcatcatggctcatatca

SEQ ID NO: 160999 - DNA, 22 bp, synthetic construct
  misc_feature 1..22: note = chemically synthesized
  source 1..22: mol_type = other DNA
agatcatcatggctcatatcaa

SEQ ID NO: 161000 - DNA, 22 bp, synthetic construct
  misc_feature 1..22: note = chemically synthesized
  source 1..22: mol_type = other DNA
gatcatcatggctcatatcaat

SEQ ID NO: 161001 - DNA, 22 bp, synthetic construct
  misc_feature 1..22: note = chemically synthesized
  source 1..22: mol_type = other DNA
atatcaatcagtgggattgtga

SEQ ID NO: 161002 - DNA, 22 bp, synthetic construct
  misc_feature 1..22: note = chemically synthesized
  source 1..22: mol_type = other DNA
tgaattctacgtgactaatgaa

SEQ ID NO: 161003 - DNA, 22 bp, synthetic construct
  misc_feature 1..22: note = chemically synthesized
  source 1..22: mol_type = other DNA
tacgtgactaatgaaagtgaga

SEQ ID NO: 161004 - DNA, 22 bp, synthetic construct
  misc_feature 1..22: note = chemically synthesized
  source 1..22: mol_type = other DNA
cgtgactaatgaaagtgagaag

SEQ ID NO: 161005 - DNA, 22 bp, synthetic construct
  misc_feature 1..22: note = chemically synthesized
  source 1..22: mol_type = other DNA
atgaaagtgagaagtgtgaaat

SEQ ID NO: 161006 - DNA, 22 bp, synthetic construct
  misc_feature 1..22: note = chemically synthesized
  source 1..22: mol_type = other DNA
ttttttctcttttattctttag

SEQ ID NO: 161007 - DNA, 22 bp, synthetic construct
  misc_feature 1..22: note = chemically synthesized
  source 1..22: mol_type = other DNA
tttctcttttattctttagccc

SEQ ID NO: 161008 - DNA, 22 bp, synthetic construct
  misc_feature 1..22: note = chemically synthesized
  source 1..22: mol_type = other DNA
ttctcttttattctttagcccc

SEQ ID NO: 161009 - DNA, 22 bp, synthetic construct
  misc_feature 1..22: note = chemically synthesized
  source 1..22: mol_type = other DNA
tctcttttattctttagcccct

SEQ ID NO: 161010 - DNA, 22 bp, synthetic construct
  misc_feature 1..22: note = chemically synthesized
  source 1..22: mol_type = other DNA
ctcttttattctttagcccctg

SEQ ID NO: 161011 - DNA, 22 bp, synthetic construct
  misc_feature 1..22: note = chemically synthesized
  source 1..22: mol_type = other DNA
tcttttattctttagcccctgg

SEQ ID NO: 161012 - DNA, 22 bp, synthetic construct
  misc_feature 1..22: note = chemically synthesized
  source 1..22: mol_type = other DNA
ttttattctttagcccctggtt

SEQ ID NO: 161013 - DNA, 22 bp, synthetic construct
  misc_feature 1..22: note = chemically synthesized
  source 1..22: mol_type = other DNA
ttattctttagcccctggttga

SEQ ID NO: 161014 - DNA, 22 bp, synthetic construct
  misc_feature 1..22: note = chemically synthesized
  source 1..22: mol_type = other DNA
tattctttagcccctggttgag

SEQ ID NO: 161015 - DNA, 22 bp, synthetic construct
  misc_feature 1..22: note = chemically synthesized
  source 1..22: mol_type = other DNA
attctttagcccctggttgagt

SEQ ID NO: 161016 - DNA, 22 bp, synthetic construct
  misc_feature 1..22: note = chemically synthesized
  source 1..22: mol_type = other DNA
ttctttagcccctggttgagtt

SEQ ID NO: 161017 - DNA, 22 bp, synthetic construct
  misc_feature 1..22: note = chemically synthesized
  source 1..22: mol_type = other DNA
tttagcccctggttgagttatt

SEQ ID NO: 161018 - DNA, 22 bp, synthetic construct
  misc_feature 1..22: note = chemically synthesized
  source 1..22: mol_type = other DNA
tagcccctggttgagttattct

SEQ ID NO: 161019 - DNA, 22 bp, synthetic construct
  misc_feature 1..22: note = chemically synthesized
  source 1..22: mol_type = other DNA
agcccctggttgagttattctt

SEQ ID NO: 161020 - DNA, 22 bp, synthetic construct
  misc_feature 1..22: note = chemically synthesized
  source 1..22: mol_type = other DNA
gcccctggttgagttattcttc

SEQ ID NO: 161021 - DNA, 22 bp, synthetic construct
  misc_feature 1..22: note = chemically synthesized
  source 1..22: mol_type = other DNA
gttgagttattcttctaagaat

SEQ ID NO: 161022 - DNA, 22 bp, synthetic construct
  misc_feature 1..22: note = chemically synthesized
  source 1..22: mol_type = other DNA
agttattcttctaagaatattt

SEQ ID NO: 161023 - DNA, 22 bp, synthetic construct
  misc_feature 1..22: note = chemically synthesized
  source 1..22: mol_type = other DNA
ttcttctaagaatatttctcca

SEQ ID NO: 161024 - DNA, 22 bp, synthetic construct
  misc_feature 1..22: note = chemically synthesized
  source 1..22: mol_type = other DNA
ttctaagaatatttctccagga

SEQ ID NO: 161025 - DNA, 22 bp, synthetic construct
  misc_feature 1..22: note = chemically synthesized
  source 1..22: mol_type = other DNA
ctaagaatatttctccaggagg

SEQ ID NO: 161026 - DNA, 22 bp, synthetic construct
  misc_feature 1..22: note = chemically synthesized
  source 1..22: mol_type = other DNA
taagaatatttctccaggagga

SEQ ID NO: 161027 - DNA, 22 bp, synthetic construct
  misc_feature 1..22: note = chemically synthesized
  source 1..22: mol_type = other DNA
agaatatttctccaggaggatt

SEQ ID NO: 161028 - DNA, 22 bp, synthetic construct
  misc_feature 1..22: note = chemically synthesized
  source 1..22: mol_type = other DNA
ctccaggaggatttataaatta

SEQ ID NO: 161029 - DNA, 22 bp, synthetic construct
  misc_feature 1..22: note = chemically synthesized
  source 1..22: mol_type = other DNA
tccaggaggatttataaattat

SEQ ID NO: 161030 - DNA, 22 bp, synthetic construct
  misc_feature 1..22: note = chemically synthesized
  source 1..22: mol_type = other DNA
caggaggatttataaattatgc

SEQ ID NO: 161031 - DNA, 22 bp, synthetic construct
  misc_feature 1..22: note = chemically synthesized
  source 1..22: mol_type = other DNA
ataaattatgcctttgtcactg

SEQ ID NO: 161032 - DNA, 22 bp, synthetic construct
  misc_feature 1..22: note = chemically synthesized
  source 1..22: mol_type = other DNA
taaattatgcctttgtcactga

SEQ ID NO: 161033 - DNA, 22 bp, synthetic construct
  misc_feature 1..22: note = chemically synthesized
  source 1..22: mol_type = other DNA
tgcctttgtcactgaatttaaa

SEQ ID NO: 161034 - DNA, 22 bp, synthetic construct
  misc_feature 1..22: note = chemically synthesized
  source 1..22: mol_type = other DNA
tgtcactgaatttaaatgcacc

SEQ ID NO: 161035 - DNA, 22 bp, synthetic construct
  misc_feature 1..22: note = chemically synthesized
  source 1..22: mol_type = other DNA
gtcactgaatttaaatgcacct

SEQ ID NO: 161036 - DNA, 22 bp, synthetic construct
  misc_feature 1..22: note = chemically synthesized
  source 1..22: mol_type = other DNA
tcactgaatttaaatgcaccta

SEQ ID NO: 161037 - DNA, 22 bp, synthetic construct
  misc_feature 1..22: note = chemically synthesized
  source 1..22: mol_type = other DNA
aatttaaatgcacctaaggctc

SEQ ID NO: 161038 - DNA, 22 bp, synthetic construct
  misc_feature 1..22: note = chemically synthesized
  source 1..22: mol_type = other DNA
aaatgcacctaaggctcgttgt

SEQ ID NO: 161039 - DNA, 22 bp, synthetic construct
  misc_feature 1..22: note = chemically synthesized
  source 1..22: mol_type = other DNA
aatgcacctaaggctcgttgtt

SEQ ID NO: 161040 - DNA, 22 bp, synthetic construct
  misc_feature 1..22: note = chemically synthesized
  source 1..22: mol_type = other DNA
aggctcgttgttctgaaacatc

SEQ ID NO: 161041 - DNA, 22 bp, synthetic construct
  misc_feature 1..22: note = chemically synthesized
  source 1..22: mol_type = other DNA
gttgttctgaaacatccaggga

SEQ ID NO: 161042 - DNA, 22 bp, synthetic construct
  misc_feature 1..22: note = chemically synthesized
  source 1..22: mol_type = other DNA
ttctgaaacatccagggactca

SEQ ID NO: 161043 - DNA, 22 bp, synthetic construct
  misc_feature 1..22: note = chemically synthesized
  source 1..22: mol_type = other DNA
tgaaacatccagggactcaatg

SEQ ID NO: 161044 - DNA, 22 bp, synthetic construct
  misc_feature 1..22: note = chemically synthesized
  source 1..22: mol_type = other DNA
aaacatccagggactcaatgaa

SEQ ID NO: 161045 - DNA, 22 bp, synthetic construct
  misc_feature 1..22: note = chemically synthesized
  source 1..22: mol_type = other DNA
aatgaaaacaagttgttgactc

SEQ ID NO: 161046 - DNA, 22 bp, synthetic construct
  misc_feature 1..22: note = chemically synthesized
  source 1..22: mol_type = other DNA
ttgactctcattttcttgatca

SEQ ID NO: 161047 - DNA, 22 bp, synthetic construct
  misc_feature 1..22: note = chemically synthesized
  source 1..22: mol_type = other DNA
actctcattttcttgatcatcc

SEQ ID NO: 161048 - DNA, 22 bp, synthetic construct
  misc_feature 1..22: note = chemically synthesized
  source 1..22: mol_type = other DNA
tcattttcttgatcatccctgc

SEQ ID NO: 161049 - DNA, 22 bp, synthetic construct
  misc_feature 1..22: note = chemically synthesized
  source 1..22: mol_type = other DNA
attttcttgatcatccctgcct

SEQ ID NO: 161050 - DNA, 22 bp, synthetic construct
  misc_feature 1..22: note = chemically synthesized
  source 1..22: mol_type = other DNA
tcttgatcatccctgccttaaa

SEQ ID NO: 161051 - DNA, 22 bp, synthetic construct
  misc_feature 1..22: note = chemically synthesized
  source 1..22: mol_type = other DNA
cttgatcatccctgccttaaaa

SEQ ID NO: 161052 - DNA, 22 bp, synthetic construct
  misc_feature 1..22: note = chemically synthesized
  source 1..22: mol_type = other DNA
ttgatcatccctgccttaaaaa

SEQ ID NO: 161053 - DNA, 22 bp, synthetic construct
  misc_feature 1..22: note = chemically synthesized
  source 1..22: mol_type = other DNA
gatcatccctgccttaaaaaaa

SEQ ID NO: 161054 - DNA, 22 bp, synthetic construct
  misc_feature 1..22: note = chemically synthesized
  source 1..22: mol_type = other DNA
atcatccctgccttaaaaaaaa

SEQ ID NO: 161055 - DNA, 22 bp, synthetic construct
  misc_feature 1..22: note = chemically synthesized
  source 1..22: mol_type = other DNA
ccttaaaaaaaaaaatcaaagg

SEQ ID NO: 161056 - DNA, 22 bp, synthetic construct
  misc_feature 1..22: note = chemically synthesized
  source 1..22: mol_type = other DNA
aaaaaaaaaaatcaaaggaagt

SEQ ID NO: 161057 - DNA, 22 bp, synthetic construct
  misc_feature 1..22: note = chemically synthesized
  source 1..22: mol_type = other DNA
aaaaaaaaaatcaaaggaagta

SEQ ID NO: 161058 - DNA, 22 bp, synthetic construct
  misc_feature 1..22: note = chemically synthesized
  source 1..22: mol_type = other DNA
actgtgttcttgtcaaagaaaa

SEQ ID NO: 161059 - DNA, 22 bp, synthetic construct
  misc_feature 1..22: note = chemically synthesized
  source 1..22: mol_type = other DNA
tgttcttgtcaaagaaaatctt

SEQ ID NO: 161060 - DNA, 22 bp, synthetic construct
  misc_feature 1..22: note = chemically synthesized
  source 1..22: mol_type = other DNA
ttgtcaaagaaaatcttatgaa

SEQ ID NO: 161061 - DNA, 22 bp, synthetic construct
  misc_feature 1..22: note = chemically synthesized
  source 1..22: mol_type = other DNA
gtcaaagaaaatcttatgaata

SEQ ID NO: 161062 - DNA, 22 bp, synthetic construct
  misc_feature 1..22: note = chemically synthesized
  source 1..22: mol_type = other DNA
tcaaagaaaatcttatgaatat

SEQ ID NO: 161063 - DNA, 22 bp, synthetic construct
  misc_feature 1..22: note = chemically synthesized
  source 1..22: mol_type = other DNA
atgaatatcaagagacaataaa

SEQ ID NO: 161064 - DNA, 22 bp, synthetic construct
  misc_feature 1..22: note = chemically synthesized
  source 1..22: mol_type = other DNA
tgaatatcaagagacaataaag

SEQ ID NO: 161065 - DNA, 22 bp, synthetic construct
  misc_feature 1..22: note = chemically synthesized
  source 1..22: mol_type = other DNA
aaaatttaaatacattttcaga

SEQ ID NO: 161066 - DNA, 22 bp, synthetic construct
  misc_feature 1..22: note = chemically synthesized
  source 1..22: mol_type = other DNA
aaatacattttcagagtcatac

SEQ ID NO: 161067 - DNA, 22 bp, synthetic construct
  misc_feature 1..22: note = chemically synthesized
  source 1..22: mol_type = other DNA
aatacattttcagagtcataca

SEQ ID NO: 161068 - DNA, 22 bp, synthetic construct
  misc_feature 1..22: note = chemically synthesized
  source 1..22: mol_type = other DNA
tcagagtcatacaaggaattac

SEQ ID NO: 161069 - DNA, 22 bp, synthetic construct
  misc_feature 1..22: note = chemically synthesized
  source 1..22: mol_type = other DNA
cagagtcatacaaggaattaca

SEQ ID NO: 161070 - DNA, 22 bp, synthetic construct
  misc_feature 1..22: note = chemically synthesized
  source 1..22: mol_type = other DNA
agagtcatacaaggaattacag

SEQ ID NO: 161071 - DNA, 22 bp, synthetic construct
  misc_feature 1..22: note = chemically synthesized
  source 1..22: mol_type = other DNA
caggcacaaaaattagaaccag

SEQ ID NO: 161072 - DNA, 22 bp, synthetic construct
  misc_feature 1..22: note = chemically synthesized
  source 1..22: mol_type = other DNA
gaaccaggtgttgcatttgaca

SEQ ID NO: 161073 - DNA, 22 bp, synthetic construct
  misc_feature 1..22: note = chemically synthesized
  source 1..22: mol_type = other DNA
catttgacacatcaatgttgtt

SEQ ID NO: 161074 - DNA, 22 bp, synthetic construct
  misc_feature 1..22: note = chemically synthesized
  source 1..22: mol_type = other DNA
gacacatcaatgttgttgtttt

SEQ ID NO: 161075 - DNA, 22 bp, synthetic construct
  misc_feature 1..22: note = chemically synthesized
  source 1..22: mol_type = other DNA
acacatcaatgttgttgttttt

SEQ ID NO: 161076 - DNA, 22 bp, synthetic construct
  misc_feature 1..22: note = chemically synthesized
  source 1..22: mol_type = other DNA
ttgtttttttttttgctaacct

SEQ ID NO: 161077 - DNA, 22 bp, synthetic construct
  misc_feature 1..22: note = chemically synthesized
  source 1..22: mol_type = other DNA
tttttttttttgctaacctcaa

SEQ ID NO: 161078 - DNA, 22 bp, synthetic construct
  misc_feature 1..22: note = chemically synthesized
  source 1..22: mol_type = other DNA
ttttttttgctaacctcaaaat

SEQ ID NO: 161079 - DNA, 22 bp, synthetic construct
  misc_feature 1..22: note = chemically synthesized
  source 1..22: mol_type = other DNA
tttttttgctaacctcaaaatt

SEQ ID NO: 161080 - DNA, 22 bp, synthetic construct
  misc_feature 1..22: note = chemically synthesized
  source 1..22: mol_type = other DNA
ttttttgctaacctcaaaattt

SEQ ID NO: 161081 - DNA, 22 bp, synthetic construct
  misc_feature 1..22: note = chemically synthesized
  source 1..22: mol_type = other DNA
tttttgctaacctcaaaattta

SEQ ID NO: 161082 - DNA, 22 bp, synthetic construct
  misc_feature 1..22: note = chemically synthesized
  source 1..22: mol_type = other DNA
ttttgctaacctcaaaatttac

SEQ ID NO: 161083 - DNA, 22 bp, synthetic construct
  misc_feature 1..22: note = chemically synthesized
  source 1..22: mol_type = other DNA
tttgctaacctcaaaatttact

SEQ ID NO: 161084 - DNA, 22 bp, synthetic construct
  misc_feature 1..22: note = chemically synthesized
  source 1..22: mol_type = other DNA
ttgctaacctcaaaatttactt

SEQ ID NO: 161085 - DNA, 22 bp, synthetic construct
  misc_feature 1..22: note = chemically synthesized
  source 1..22: mol_type = other DNA
tgctaacctcaaaatttacttc

SEQ ID NO: 161086 - DNA, 22 bp, synthetic construct
  misc_feature 1..22: note = chemically synthesized
  source 1..22: mol_type = other DNA
gctaacctcaaaatttacttct

SEQ ID NO: 161087 - DNA, 22 bp, synthetic construct
  misc_feature 1..22: note = chemically synthesized
  source 1..22: mol_type = other DNA
ctaacctcaaaatttacttctt

SEQ ID NO: 161088 - DNA, 22 bp, synthetic construct
  misc_feature 1..22: note = chemically synthesized
  source 1..22: mol_type = other DNA
acctcaaaatttacttctttat

SEQ ID NO: 161089 - DNA, 22 bp, synthetic construct
  misc_feature 1..22: note = chemically synthesized
  source 1..22: mol_type = other DNA
aaaatttacttctttattaatt

SEQ ID NO: 161090 - DNA, 22 bp, synthetic construct
  misc_feature 1..22: note = chemically synthesized
  source 1..22: mol_type = other DNA
acttctttattaattcatcatt

SEQ ID NO: 161091 - DNA, 22 bp, synthetic construct
  misc_feature 1..22: note = chemically synthesized
  source 1..22: mol_type = other DNA
cttctttattaattcatcattt

SEQ ID NO: 161092 - DNA, 22 bp, synthetic construct
  misc_feature 1..22: note = chemically synthesized
  source 1..22: mol_type = other DNA
ctttattaattcatcattttat

SEQ ID NO: 161093 - DNA, 22 bp, synthetic construct
  misc_feature 1..22: note = chemically synthesized
  source 1..22: mol_type = other DNA
tttattaattcatcattttatc

SEQ ID NO: 161094 - DNA, 22 bp, synthetic construct
  misc_feature 1..22: note = chemically synthesized
  source 1..22: mol_type = other DNA
tattaattcatcattttatcaa

SEQ ID NO: 161095 - DNA, 22 bp, synthetic construct
  misc_feature 1..22: note = chemically synthesized
  source 1..22: mol_type = other DNA
attaattcatcattttatcaaa

SEQ ID NO: 161096 - DNA, 22 bp, synthetic construct
  misc_feature 1..22: note = chemically synthesized
  source 1..22: mol_type = other DNA
ttaattcatcattttatcaaaa

SEQ ID NO: 161097 - DNA, 22 bp, synthetic construct
  misc_feature 1..22: note = chemically synthesized
  source 1..22: mol_type = other DNA
attcatcattttatcaaaaacc

SEQ ID NO: 161098 - DNA, 22 bp, synthetic construct
  misc_feature 1..22: note = chemically synthesized
  source 1..22: mol_type = other DNA
atcattttatcaaaaacctgca

SEQ ID NO: 161099 - DNA, 22 bp, synthetic construct
  misc_feature 1..22: note = chemically synthesized
  source 1..22: mol_type = other DNA
tatcaaaaacctgcaatattaa

SEQ ID NO: 161100 - DNA, 22 bp, synthetic construct
  misc_feature 1..22: note = chemically synthesized
  source 1..22: mol_type = other DNA
atcaaaaacctgcaatattaaa

SEQ ID NO: 161101 - DNA, 22 bp, synthetic construct
  misc_feature 1..22: note = chemically synthesized
  source 1..22: mol_type = other DNA
tcaaaaacctgcaatattaaaa

SEQ ID NO: 161102 - DNA, 22 bp, synthetic construct
  misc_feature 1..22: note = chemically synthesized
  source 1..22: mol_type = other DNA
caatattaaaaatactatacta

SEQ ID NO: 161103 - DNA, 22 bp, synthetic construct
  misc_feature 1..22: note = chemically synthesized
  source 1..22: mol_type = other DNA
aaaatactatactacagaatcg

SEQ ID NO: 161104 - DNA, 22 bp, synthetic construct
  misc_feature 1..22: note = chemically synthesized
  source 1..22: mol_type = other DNA
tactacagaatcgtgacataat

SEQ ID NO: 161105 - DNA, 22 bp, synthetic construct
  misc_feature 1..22: note = chemically synthesized
  source 1..22: mol_type = other DNA
cagaatcgtgacataatagtaa

SEQ ID NO: 161106 - DNA, 22 bp, synthetic construct
  misc_feature 1..22: note = chemically synthesized
  source 1..22: mol_type = other DNA
gcacagtgaataattctcatga

SEQ ID NO: 161107 - DNA, 22 bp, synthetic construct
  misc_feature 1..22: note = chemically synthesized
  source 1..22: mol_type = other DNA
tcatgagtttgtacctatgtaa

SEQ ID NO: 161108 - DNA, 22 bp, synthetic construct
  misc_feature 1..22: note = chemically synthesized
  source 1..22: mol_type = other DNA
atgagtttgtacctatgtaatt

SEQ ID NO: 161109 - DNA, 22 bp, synthetic construct
  misc_feature 1..22: note = chemically synthesized
  source 1..22: mol_type = other DNA
gtacctatgtaattctggaaaa

SEQ ID NO: 161110 - DNA, 22 bp, synthetic construct
  misc_feature 1..22: note = chemically synthesized
  source 1..22: mol_type = other DNA
tacctatgtaattctggaaaag

SEQ ID NO: 161111 - DNA, 22 bp, synthetic construct
  misc_feature 1..22: note = chemically synthesized
  source 1..22: mol_type = other DNA
tgtaattctggaaaagagagac

SEQ ID NO: 161112 - DNA, 22 bp, synthetic construct
  misc_feature 1..22: note = chemically synthesized
  source 1..22: mol_type = other DNA
tggaaaagagagactgaaagga

SEQ ID NO: 161113 - DNA, 22 bp, synthetic construct
  misc_feature 1..22: note = chemically synthesized
  source 1..22: mol_type = other DNA
gaaaagagagactgaaaggaag

SEQ ID NO: 161114 - DNA, 22 bp, synthetic construct
  misc_feature 1..22: note = chemically synthesized
  source 1..22: mol_type = other DNA
aaaggaagagaggtggggaatg

SEQ ID NO: 161115 - DNA, 22 bp, synthetic construct
  misc_feature 1..22: note = chemically synthesized
  source 1..22: mol_type = other DNA
agagagaatgaagcattgaaat

SEQ ID NO: 161116 - DNA, 22 bp, synthetic construct
  misc_feature 1..22: note = chemically synthesized
  source 1..22: mol_type = other DNA
aaatctaaccaaagcaggggag

SEQ ID NO: 161117 - DNA, 22 bp, synthetic construct
  misc_feature 1..22: note = chemically synthesized
  source 1..22: mol_type = other DNA
accaaagcaggggagttgcatt

SEQ ID NO: 161118 - DNA, 22 bp, synthetic construct
  misc_feature 1..22: note = chemically synthesized
  source 1..22: mol_type = other DNA
catttattgtattttgtttttt

SEQ ID NO: 161119 - DNA, 22 bp, synthetic construct
  misc_feature 1..22: note = chemically synthesized
  source 1..22: mol_type = other DNA
attgtattttgttttttggtta

SEQ ID NO: 161120 - DNA, 22 bp, synthetic construct
  misc_feature 1..22: note = chemically synthesized
  source 1..22: mol_type = other DNA
ttgtattttgttttttggttag

SEQ ID NO: 161121 - DNA, 22 bp, synthetic construct
  misc_feature 1..22: note = chemically synthesized
  source 1..22: mol_type = other DNA
tattttgttttttggttaggta

SEQ ID NO: 161122 - DNA, 22 bp, synthetic construct
  misc_feature 1..22: note = chemically synthesized
  source 1..22: mol_type = other DNA
tgttttttggttaggtagttac

SEQ ID NO: 161123 - DNA, 22 bp, synthetic construct
  misc_feature 1..22: note = chemically synthesized
  source 1..22: mol_type = other DNA
gttttttggttaggtagttacc

SEQ ID NO: 161124 - DNA, 22 bp, synthetic construct
  misc_feature 1..22: note = chemically synthesized
  source 1..22: mol_type = other DNA
ttttttggttaggtagttacct

SEQ ID NO: 161125 - DNA, 22 bp, synthetic construct
  misc_feature 1..22: note = chemically synthesized
  source 1..22: mol_type = other DNA
tttggttaggtagttacctctg

SEQ ID NO: 161126 - DNA, 22 bp, synthetic construct
  misc_feature 1..22: note = chemically synthesized
  source 1..22: mol_type = other DNA
ttggttaggtagttacctctga

SEQ ID NO: 161127 - DNA, 22 bp, synthetic construct
  misc_feature 1..22: note = chemically synthesized
  source 1..22: mol_type = other DNA
tggttaggtagttacctctgat

SEQ ID NO: 161128 - DNA, 22 bp, synthetic construct
  misc_feature 1..22: note = chemically synthesized
  source 1..22: mol_type = other DNA
ggttaggtagttacctctgatt

SEQ ID NO: 161129 - DNA, 22 bp, synthetic construct
  misc_feature 1..22: note = chemically synthesized
  source 1..22: mol_type = other DNA
gttaggtagttacctctgattc

SEQ ID NO: 161130 - DNA, 22 bp, synthetic construct
  misc_feature 1..22: note = chemically synthesized
  source 1..22: mol_type = other DNA
ggtagttacctctgattcttga

SEQ ID NO: 161131 - DNA, 22 bp, synthetic construct
  misc_feature 1..22: note = chemically synthesized
  source 1..22: mol_type = other DNA
cctctgattcttgaggaatgat

SEQ ID NO: 161132 - DNA, 22 bp, synthetic construct
  misc_feature 1..22: note = chemically synthesized
  source 1..22: mol_type = other DNA
tgattcttgaggaatgatggat

SEQ ID NO: 161133 - DNA, 22 bp, synthetic construct
  misc_feature 1..22: note = chemically synthesized
  source 1..22: mol_type = other DNA
attcttgaggaatgatggatga

SEQ ID NO: 161134 - DNA, 22 bp, synthetic construct
  misc_feature 1..22: note = chemically synthesized
  source 1..22: mol_type = other DNA
ttgaggaatgatggatgagtag

SEQ ID NO: 161135 - DNA, 22 bp, synthetic construct
  misc_feature 1..22: note = chemically synthesized
  source 1..22: mol_type = other DNA
gaggaatgatggatgagtagcc

SEQ ID NO: 161136 - DNA, 22 bp, synthetic construct
  misc_feature 1..22: note = chemically synthesized
  source 1..22: mol_type = other DNA
aggaatgatggatgagtagcca

SEQ ID NO: 161137 - DNA, 22 bp, synthetic construct
  misc_feature 1..22: note = chemically synthesized
  source 1..22: mol_type = other DNA
aaactagataatgtagtttaag

SEQ ID NO: 161138 - DNA, 22 bp, synthetic construct
  misc_feature 1..22: note = chemically synthesized
  source 1..22: mol_type = other DNA
aactagataatgtagtttaagg

SEQ ID NO: 161139 - DNA, 22 bp, synthetic construct
  misc_feature 1..22: note = chemically synthesized
  source 1..22: mol_type = other DNA
gataatgtagtttaaggtaact

SEQ ID NO: 161140 - DNA, 22 bp, synthetic construct
  misc_feature 1..22: note = chemically synthesized
  source 1..22: mol_type = other DNA
aaggtaactctagttttttcaa

SEQ ID NO: 161141 - DNA, 22 bp, synthetic construct
  misc_feature 1..22: note = chemically synthesized
  source 1..22: mol_type = other DNA
aggtaactctagttttttcaat

SEQ ID NO: 161142 - DNA, 22 bp, synthetic construct
  misc_feature 1..22: note = chemically synthesized
  source 1..22: mol_type = other DNA
tagttttttcaatatggtatga

SEQ ID NO: 161143 - DNA, 22 bp, synthetic construct
  misc_feature 1..22: note = chemically synthesized
  source 1..22: mol_type = other DNA
gttttttcaatatggtatgagt

SEQ ID NO: 161144 - DNA, 22 bp, synthetic construct
  misc_feature 1..22: note = chemically synthesized
  source 1..22: mol_type = other DNA
tttcaatatggtatgagtgcaa

SEQ ID NO: 161145 - DNA, 22 bp, synthetic construct
  misc_feature 1..22: note = chemically synthesized
  source 1..22: mol_type = other DNA
ttcaatatggtatgagtgcaag

SEQ ID NO: 161146 - DNA, 22 bp, synthetic construct
  misc_feature 1..22: note = chemically synthesized
  source 1..22: mol_type = other DNA
tcaatatggtatgagtgcaagg

SEQ ID NO: 161147 - DNA, 22 bp, synthetic construct
  misc_feature 1..22: note = chemically synthesized
  source 1..22: mol_type = other DNA
caatatggtatgagtgcaaggt

SEQ ID NO: 161148 - DNA, 22 bp, synthetic construct
  misc_feature 1..22: note = chemically synthesized
  source 1..22: mol_type = other DNA
aatatggtatgagtgcaaggta

SEQ ID NO: 161149 - DNA, 22 bp, synthetic construct
  misc_feature 1..22: note = chemically synthesized
  source 1..22: mol_type = other DNA
ggggagacaaggaaaatatgaa

SEQ ID NO: 161150 - DNA, 22 bp, synthetic construct
  misc_feature 1..22: note = chemically synthesized
  source 1..22: mol_type = other DNA
gggagacaaggaaaatatgaat

SEQ ID NO: 161151 - DNA, 22 bp, synthetic construct
  misc_feature 1..22: note = chemically synthesized
  source 1..22: mol_type = other DNA
ttaatgttgtgcagagttgctg

SEQ ID NO: 161152 - DNA, 22 bp, synthetic construct
  misc_feature 1..22: note = chemically synthesized
  source 1..22: mol_type = other DNA
atgttgtgcagagttgctggac

SEQ ID NO: 161153 - DNA, 22 bp, synthetic construct
  misc_feature 1..22: note = chemically synthesized
  source 1..22: mol_type = other DNA
tgcagagttgctggactttatt

SEQ ID NO: 161154 - DNA, 22 bp, synthetic construct
  misc_feature 1..22: note = chemically synthesized
  source 1..22: mol_type = other DNA
ctggactttattccaaaagcta

SEQ ID NO: 161155 - DNA, 22 bp, synthetic construct
  misc_feature 1..22: note = chemically synthesized
  source 1..22: mol_type = other DNA
gactttattccaaaagctataa

SEQ ID NO: 161156 - DNA, 22 bp, synthetic construct
  misc_feature 1..22: note = chemically synthesized
  source 1..22: mol_type = other DNA
tattccaaaagctataatgtgc

SEQ ID NO: 161157 - DNA, 22 bp, synthetic construct
  misc_feature 1..22: note = chemically synthesized
  source 1..22: mol_type = other DNA
attccaaaagctataatgtgcc

SEQ ID NO: 161158 - DNA, 22 bp, synthetic construct
  misc_feature 1..22: note = chemically synthesized
  source 1..22: mol_type = other DNA
ttccaaaagctataatgtgcca

SEQ ID NO: 161159 - DNA, 22 bp, synthetic construct
  misc_feature 1..22: note = chemically synthesized
  source 1..22: mol_type = other DNA
caaaagctataatgtgccattg

SEQ ID NO: 161160 - DNA, 22 bp, synthetic construct
  misc_feature 1..22: note = chemically synthesized
  source 1..22: mol_type = other DNA
taatgtgccattggagagtatt

SEQ ID NO: 161161 - DNA, 22 bp, synthetic construct
  misc_feature 1..22: note = chemically synthesized
  source 1..22: mol_type = other DNA
gagagtattcatttgtttgctt

SEQ ID NO: 161162 - DNA, 22 bp, synthetic construct
  misc_feature 1..22: note = chemically synthesized
  source 1..22: mol_type = other DNA
atttgtttgcttgtgttctaca

SEQ ID NO: 161163 - DNA, 22 bp, synthetic construct
  misc_feature 1..22: note = chemically synthesized
  source 1..22: mol_type = other DNA
gtttgcttgtgttctacaagta

SEQ ID NO: 161164 - DNA, 22 bp, synthetic construct
  misc_feature 1..22: note = chemically synthesized
  source 1..22: mol_type = other DNA
tttgcttgtgttctacaagtaa

SEQ ID NO: 161165 - DNA, 22 bp, synthetic construct
  misc_feature 1..22: note = chemically synthesized
  source 1..22: mol_type = other DNA
gcttgtgttctacaagtaagac

SEQ ID NO: 161166 - DNA, 22 bp, synthetic construct
  misc_feature 1..22: note = chemically synthesized
  source 1..22: mol_type = other DNA
cttgtgttctacaagtaagacg

SEQ ID NO: 161167 - DNA, 22 bp, synthetic construct
  misc_feature 1..22: note = chemically synthesized
  source 1..22: mol_type = other DNA
gtgttctacaagtaagacgtgt

SEQ ID NO: 161168 - DNA, 22 bp, synthetic construct
  misc_feature 1..22: note = chemically synthesized
  source 1..22: mol_type = other DNA
tgttctacaagtaagacgtgtg

SEQ ID NO: 161169 - DNA, 22 bp, synthetic construct
  misc_feature 1..22: note = chemically synthesized
  source 1..22: mol_type = other DNA
tacaagtaagacgtgtgtgtgt

SEQ ID NO: 161170 - DNA, 22 bp, synthetic construct
  misc_feature 1..22: note = chemically synthesized
  source 1..22: mol_type = other DNA
caagtaagacgtgtgtgtgtgt

SEQ ID NO: 161171 - DNA, 22 bp, synthetic construct
  misc_feature 1..22: note = chemically synthesized
  source 1..22: mol_type = other DNA
cttgggcatgtggcagcatacc

SEQ ID NO: 161172 - DNA, 22 bp, synthetic construct
  misc_feature 1..22: note = chemically synthesized
  source 1..22: mol_type = other DNA
gggcatgtggcagcataccaca

SEQ ID NO: 161173 - DNA, 22 bp, synthetic construct
  misc_feature 1..22: note = chemically synthesized
  source 1..22: mol_type = other DNA
ggcatgtggcagcataccacac

SEQ ID NO: 161174 - DNA, 22 bp, synthetic construct
  misc_feature 1..22: note = chemically synthesized
  source 1..22: mol_type = other DNA
gggctattgtgttagtgaagag

SEQ ID NO: 161175 - DNA, 22 bp, synthetic construct
  misc_feature 1..22: note = chemically synthesized
  source 1..22: mol_type = other DNA
ttgtgttagtgaagaggaggac

SEQ ID NO: 161176 - DNA, 22 bp, synthetic construct
  misc_feature 1..22: note = chemically synthesized
  source 1..22: mol_type = other DNA
tgttagtgaagaggaggactat

SEQ ID NO: 161177 - DNA, 22 bp, synthetic construct
  misc_feature 1..22: note = chemically synthesized
  source 1..22: mol_type = other DNA
gtgaagaggaggactatattgt

SEQ ID NO: 161178 - DNA, 22 bp, synthetic construct
  misc_feature 1..22: note = chemically synthesized
  source 1..22: mol_type = other DNA
tattgtctaaaattagtggcat

SEQ ID NO: 161179 - DNA, 22 bp, synthetic construct
  misc_feature 1..22: note = chemically synthesized
  source 1..22: mol_type = other DNA
tctaaaattagtggcataagaa

SEQ ID NO: 161180 - DNA, 22 bp, synthetic construct
  misc_feature 1..22: note = chemically synthesized
  source 1..22: mol_type = other DNA
aaattagtggcataagaattta

SEQ ID NO: 161181 - DNA, 22 bp, synthetic construct
  misc_feature 1..22: note = chemically synthesized
  source 1..22: mol_type = other DNA
gtggcataagaatttacggcta

SEQ ID NO: 161182 - DNA, 22 bp, synthetic construct
  misc_feature 1..22: note = chemically synthesized
  source 1..22: mol_type = other DNA
acggctagtcaattgttcttga

SEQ ID NO: 161183 - DNA, 22 bp, synthetic construct
  misc_feature 1..22: note = chemically synthesized
  source 1..22: mol_type = other DNA
cggctagtcaattgttcttgaa

SEQ ID NO: 161184 - DNA, 22 bp, synthetic construct
  misc_feature 1..22: note = chemically synthesized
  source 1..22: mol_type = other DNA
gtcaattgttcttgaaaaacct

SEQ ID NO: 161185 - DNA, 22 bp, synthetic construct
  misc_feature 1..22: note = chemically synthesized
  source 1..22: mol_type = other DNA
ttcttgaaaaacctcaggtcat

SEQ ID NO: 161186 - DNA, 22 bp, synthetic construct
  misc_feature 1..22: note = chemically synthesized
  source 1..22: mol_type = other DNA
ttgaaaaacctcaggtcataga

SEQ ID NO: 161187 - DNA, 22 bp, synthetic construct
  misc_feature 1..22: note = chemically synthesized
  source 1..22: mol_type = other DNA
gaaaaacctcaggtcatagatc

SEQ ID NO: 161188 - DNA, 22 bp, synthetic construct
  misc_feature 1..22: note = chemically synthesized
  source 1..22: mol_type = other DNA
aaaaacctcaggtcatagatca

SEQ ID NO: 161189 - DNA, 22 bp, synthetic construct
  misc_feature 1..22: note = chemically synthesized
  source 1..22: mol_type = other DNA
aggtcatagatcatttttttca

SEQ ID NO: 161190 - DNA, 22 bp, synthetic construct
  misc_feature 1..22: note = chemically synthesized
  source 1..22: mol_type = other DNA
ttttcaaggttatggaaaatat

SEQ ID NO: 161191 - DNA, 22 bp, synthetic construct
  misc_feature 1..22: note = chemically synthesized
  source 1..22: mol_type = other DNA
tttcaaggttatggaaaatatt

SEQ ID NO: 161192 - DNA, 22 bp, synthetic construct
  misc_feature 1..22: note = chemically synthesized
  source 1..22: mol_type = other DNA
ttcaaggttatggaaaatattc

SEQ ID NO: 161193 - DNA, 22 bp, synthetic construct
  misc_feature 1..22: note = chemically synthesized
  source 1..22: mol_type = other DNA
tcaaggttatggaaaatattca

SEQ ID NO: 161194 - DNA, 22 bp, synthetic construct
  misc_feature 1..22: note = chemically synthesized
  source 1..22: mol_type = other DNA
caaggttatggaaaatattcac

SEQ ID NO: 161195 - DNA, 22 bp, synthetic construct
  misc_feature 1..22: note = chemically synthesized
  source 1..22: mol_type = other DNA
aaggttatggaaaatattcaca

SEQ ID NO: 161196 - DNA, 22 bp, synthetic construct
  misc_feature 1..22: note = chemically synthesized
  source 1..22: mol_type = other DNA
tggaaaatattcacatatgggc

SEQ ID NO: 161197 - DNA, 22 bp, synthetic construct
  misc_feature 1..22: note = chemically synthesized
  source 1..22: mol_type = other DNA
acatatgggcagatgtccatac

SEQ ID NO: 161198 - skipped

SEQ ID NO: 161199 - protein, 9 aa, synthetic construct
  REGION 1..9: note = chemically synthesized
LAGLIDADG

SEQ ID NO: 161200 - DNA, 19 bp, synthetic construct
  misc_feature 1..19: note = guide
  source 1..19: mol_type = other DNA
cagaaatagtgcgtccttt

SEQ ID NO: 161201 - DNA, 19 bp, synthetic construct
  misc_feature 1..19: note = Guide
  source 1..19: mol_type = other DNA
aaggacgcactatttctga

SEQ ID NO: 161202 - DNA, 19 bp, synthetic construct
  misc_feature 1..19: note = Guide
  source 1..19: mol_type = other DNA
caagaaaagagagaactcg

SEQ ID NO: 161203 - DNA, 19 bp, synthetic construct
  misc_feature 1..19: note = Guide
  source 1..19: mol_type = other DNA
aaaagagagaactcgtggg

SEQ ID NO: 161204 - DNA, 19 bp, synthetic construct
  misc_feature 1..19: note = Guide
  source 1..19: mol_type = other DNA
aactcgtgggtggatttag

SEQ ID NO: 161205 - DNA, 19 bp, synthetic construct
  misc_feature 1..19: note = Guide
  source 1..19: mol_type = other DNA
ctcgtgggtggatttagtg

SEQ ID NO: 161206 - DNA, 19 bp, synthetic construct
  misc_feature 1..19: note = Guide
  source 1..19: mol_type = other DNA
tagtggggtagttactcct

SEQ ID NO: 161207 - DNA, 19 bp, synthetic construct
  misc_feature 1..19: note = Guide
  source 1..19: mol_type = other DNA
ggtcaatggaggtactctt

SEQ ID NO: 161208 - DNA, 19 bp, synthetic construct
  misc_feature 1..19: note = Guide
  source 1..19: mol_type = other DNA
actcaggatatagctcatt

SEQ ID NO: 161209 - DNA, 19 bp, synthetic construct
  misc_feature 1..19: note = Guide
  source 1..19: mol_type = other DNA
tttctcttaacgtcttcaa

SEQ ID NO: 161210 - DNA, 19 bp, synthetic construct
  misc_feature 1..19: note = Guide
  source 1..19: mol_type = other DNA
ctaacttgggtatagtcag

SEQ ID NO: 161211 - DNA, 19 bp, synthetic construct
  misc_feature 1..19: note = Guide
  source 1..19: mol_type = other DNA
caagccccctgtttggatc

SEQ ID NO: 161212 - DNA, 19 bp, synthetic construct
  misc_feature 1..19: note = Guide
  source 1..19: mol_type = other DNA
attgccagatccaaacagg

SEQ ID NO: 161213 - DNA, 19 bp, synthetic construct
  misc_feature 1..19: note = Guide
  source 1..19: mol_type = other DNA
cattgccagatccaaacag

SEQ ID NO: 161214 - DNA, 19 bp, synthetic construct
  misc_feature 1..19: note = Guide
  source 1..19: mol_type = other DNA
tcattgccagatccaaaca

SEQ ID NO: 161215 - DNA, 19 bp, synthetic construct
  misc_feature 1..19: note = Guide
  source 1..19: mol_type = other DNA
ttcattgccagatccaaac

SEQ ID NO: 161216 - DNA, 19 bp, synthetic construct
  misc_feature 1..19: note = Guide
  source 1..19: mol_type = other DNA
tcctaagggtcttgggtac

SEQ ID NO: 161217 - DNA, 19 bp, synthetic construct
  misc_feature 1..19: note = Guide
  source 1..19: mol_type = other DNA
ggtgctacatacttcctaa

SEQ ID NO: 161218 - DNA, 19 bp, synthetic construct
  misc_feature 1..19: note = Guide
  source 1..19: mol_type = other DNA
tatggtgaggtgagctctt

SEQ ID NO: 161219 - DNA, 19 bp, synthetic construct
  misc_feature 1..19: note = Guide
  source 1..19: mol_type = other DNA
ctcaccatatctcttgagt

SEQ ID NO: 161220 - DNA, 19 bp, synthetic construct
  misc_feature 1..19: note = Guide
  source 1..19: mol_type = other DNA
gtgggagcacatagatagg

SEQ ID NO: 161221 - DNA, 19 bp, synthetic construct
  misc_feature 1..19: note = Guide
  source 1..19: mol_type = other DNA
gctttgtgggttattagtg

SEQ ID NO: 161222 - DNA, 19 bp, synthetic construct
  misc_feature 1..19: note = Guide
  source 1..19: mol_type = other DNA
ctgctttgtgggttattag

SEQ ID NO: 161223 - DNA, 19 bp, synthetic construct
  misc_feature 1..19: note = Guide
  source 1..19: mol_type = other DNA
attattgtacatgagcaac

SEQ ID NO: 161224 - DNA, 19 bp, synthetic construct
  misc_feature 1..19: note = Guide
  source 1..19: mol_type = other DNA
acataagtacacatcttac

SEQ ID NO: 161225 - DNA, 19 bp, synthetic construct
  misc_feature 1..19: note = Guide
  source 1..19: mol_type = other DNA
ccagtcaatctagagaatt

SEQ ID NO: 161226 - DNA, 19 bp, synthetic construct
  misc_feature 1..19: note = Guide
  source 1..19: mol_type = other DNA
aaattctctagattgactg

SEQ ID NO: 161227 - DNA, 19 bp, synthetic construct
  misc_feature 1..19: note = Guide
  source 1..19: mol_type = other DNA
caaattctctagattgact

SEQ ID NO: 161228 - DNA, 19 bp, synthetic construct
  misc_feature 1..19: note = Guide
  source 1..19: mol_type = other DNA
ccaaattctctagattgac

SEQ ID NO: 161229 - DNA, 19 bp, synthetic construct
  misc_feature 1..19: note = Guide
  source 1..19: mol_type = other DNA
acatgctgttcatttactc

SEQ ID NO: 161230 - DNA, 19 bp, synthetic construct
  misc_feature 1..19: note = Guide
  source 1..19: mol_type = other DNA
acctaaactgaggaacctt

SEQ ID NO: 161231 - DNA, 19 bp, synthetic construct
  misc_feature 1..19: note = Guide
  source 1..19: mol_type = other DNA
tatcagttagggtccatca

SEQ ID NO: 161232 - DNA, 19 bp, synthetic construct
  misc_feature 1..19: note = Guide
  source 1..19: mol_type = other DNA
gttagggtccatcaaggaa

SEQ ID NO: 161233 - DNA, 19 bp, synthetic construct
  misc_feature 1..19: note = chemically synthesized
  source 1..19: mol_type = other DNA
actgctgtcaatgccctgt

SEQ ID NO: 161234 - DNA, 19 bp, synthetic construct
  misc_feature 1..19: note = chemically synthesized
  source 1..19: mol_type = other DNA
aagtgaacgtggatgcagt

SEQ ID NO: 161235 - DNA, 19 bp, synthetic construct
  misc_feature 1..19: note = chemically synthesized
  source 1..19: mol_type = other DNA
tttcctaccctcagattac

SEQ ID NO: 161236 - DNA, 19 bp, synthetic construct
  misc_feature 1..19: note = chemically synthesized
  source 1..19: mol_type = other DNA
ccaccagtaatctgagggt

SEQ ID NO: 161237 - DNA, 19 bp, synthetic construct
  misc_feature 1..19: note = chemically synthesized
  source 1..19: mol_type = other DNA
tagaccaccagtaatctga

SEQ ID NO: 161238 - DNA, 19 bp, synthetic construct
  misc_feature 1..19: note = chemically synthesized
  source 1..19: mol_type = other DNA
ttaaaatagcaagattgtg

SEQ ID NO: 161239 - DNA, 19 bp, synthetic construct
  misc_feature 1..19: note = chemically synthesized
  source 1..19: mol_type = other DNA
ttgtctctccacatgggta

SEQ ID NO: 161240 - DNA, 19 bp, synthetic construct
  misc_feature 1..19: note = chemically synthesized
  source 1..19: mol_type = other DNA
tgtctctccacatgggtat

SEQ ID NO: 161241 - DNA, 19 bp, synthetic construct
  misc_feature 1..19: note = chemically synthesized
  source 1..19: mol_type = other DNA
agcctctcccatacccatg

SEQ ID NO: 161242 - DNA, 19 bp, synthetic construct
  misc_feature 1..19: note = chemically synthesized
  source 1..19: mol_type = other DNA
tggggcagaagtcgttgct

SEQ ID NO: 161243 - DNA, 19 bp, synthetic construct
  misc_feature 1..19: note = chemically synthesized
  source 1..19: mol_type = other DNA
atgctgatgggaataacct

SEQ ID NO: 161244 - DNA, 19 bp, synthetic construct
  misc_feature 1..19: note = chemically synthesized
  source 1..19: mol_type = other DNA
ctggcccgcaactttggca

SEQ ID NO: 161245 - DNA, 19 bp, synthetic construct
  misc_feature 1..19: note = chemically synthesized
  source 1..19: mol_type = other DNA
aattccttgccaaagttgc

SEQ ID NO: 161246 - DNA, 19 bp, synthetic construct
  misc_feature 1..19: note = chemically synthesized
  source 1..19: mol_type = other DNA
gaattccttgccaaagttg

SEQ ID NO: 161247 - DNA, 19 bp, synthetic construct
  misc_feature 1..19: note = chemically synthesized
  source 1..19: mol_type = other DNA
caatggtacttgtgagcca

SEQ ID NO: 161248 - DNA, 19 bp, synthetic construct
  misc_feature 1..19: note = Artificial Sequence
  source 1..19: mol_type = other DNA
ggttatcaggaaacagtcc

SEQ ID NO: 161249 - DNA, 19 bp, synthetic construct
  misc_feature 1..19: note = chemically synthesized
  source 1..19: mol_type = other DNA
gggtcttcttatggttatc

SEQ ID NO: 161250 - DNA, 19 bp, synthetic construct
  misc_feature 1..19: note = chemically synthesized
  source 1..19: mol_type = other DNA
gggaaatagggtcttctta

SEQ ID NO: 161251 - DNA, 19 bp, synthetic construct
  misc_feature 1..19: note = Artificial Sequence
  source 1..19: mol_type = other DNA
aggaaccttcttacacacc

SEQ ID NO: 161252 - DNA, 19 bp, synthetic construct
  misc_feature 1..19: note = chemically synthesized
  source 1..19: mol_type = other DNA
ttcctgaggctctacagat

SEQ ID NO: 161253 - DNA, 19 bp, synthetic construct
  misc_feature 1..19: note = Artificial Sequence
  source 1..19: mol_type = other DNA
tccctatctgtagagcctc

SEQ ID NO: 161254 - DNA, 19 bp, synthetic construct
  misc_feature 1..19: note = Artificial Sequence
  source 1..19: mol_type = other DNA
aaagcaagggaaccgtaca

SEQ ID NO: 161255 - DNA, 19 bp, synthetic construct
  misc_feature 1..19: note = chemically synthesized
  source 1..19: mol_type = other DNA
cacccattaatgccttgta

SEQ ID NO: 161256 - DNA, 19 bp, synthetic construct
  misc_feature 1..19: note = chemically synthesized
  source 1..19: mol_type = other DNA
aatcgtagcattacccttg

SEQ ID NO: 161257 - DNA, 19 bp, synthetic construct
  misc_feature 1..19: note = chemically synthesized
  source 1..19: mol_type = other DNA
ttgatggggtatagtatta

SEQ ID NO: 161258 - DNA, 19 bp, synthetic construct
  misc_feature 1..19: note = chemically synthesized
  source 1..19: mol_type = other DNA
ggagcaggaacacttgatg

SEQ ID NO: 161259 - DNA, 19 bp, synthetic construct
  misc_feature 1..19: note = chemically synthesized
  source 1..19: mol_type = other DNA
tggagcaggaacacttgat

SEQ ID NO: 161260 - DNA, 19 bp, synthetic construct
  misc_feature 1..19: note = chemically synthesized
  source 1..19: mol_type = other DNA
tagagaagtttattgtggc

SEQ ID NO: 161261 - DNA, 19 bp, synthetic construct
  misc_feature 1..19: note = chemically synthesized
  source 1..19: mol_type = other DNA
acaaagaaacactgtgcga

SEQ ID NO: 161262 - DNA, 19 bp, synthetic construct
  misc_feature 1..19: note = chemically synthesized
  source 1..19: mol_type = other DNA
acacattgtcagtatattc

SEQ ID NO: 161263 - DNA, 19 bp, synthetic construct
  misc_feature 1..19: note = chemically synthesized
  source 1..19: mol_type = other DNA
gaaaacctcttccgccatt

SEQ ID NO: 161264 - DNA, 19 bp, synthetic construct
  misc_feature 1..19: note = chemically synthesized
  source 1..19: mol_type = other DNA
ctaggcctaatggcggaag

SEQ ID NO: 161265 - DNA, 19 bp, synthetic construct
  misc_feature 1..19: note = Chemically synthesized
  source 1..19: mol_type = other DNA
ttccgccattaggcctaga

SEQ ID NO: 161266 - DNA, 19 bp, synthetic construct
  misc_feature 1..19: note = Chemically synthesized
  source 1..19: mol_type = other DNA
tccgccattaggcctagaa

SEQ ID NO: 161267 - DNA, 19 bp, synthetic construct
  misc_feature 1..19: note = Chemically synthesized
  source 1..19: mol_type = other DNA
gcccttctaggcctaatgg

SEQ ID NO: 161268 - DNA, 19 bp, synthetic construct
  misc_feature 1..19: note = Chemically synthesized
  source 1..19: mol_type = other DNA
gacctctggttatgggctc

SEQ ID NO: 161269 - DNA, 19 bp, synthetic construct
  misc_feature 1..19: note = Chemically synthesized
  source 1..19: mol_type = other DNA
ccagtggacctctggttat

SEQ ID NO: 161270 - DNA, 19 bp, synthetic construct
  misc_feature 1..19: note = Chemically synthesized
  source 1..19: mol_type = other DNA
actgaatccagtggacctc

SEQ ID NO: 161271 - DNA, 19 bp, synthetic construct
  misc_feature 1..19: note = Chemically synthesized
  source 1..19: mol_type = other DNA
ctggattcagtgagctagt

SEQ ID NO: 161272 - DNA, 19 bp, synthetic construct
  misc_feature 1..19: note = Chemically synthesized
  source 1..19: mol_type = other DNA
gagagccagaactgtctaa

SEQ ID NO: 161273 - DNA, 19 bp, synthetic construct
  misc_feature 1..19: note = Chemically synthesized
  source 1..19: mol_type = other DNA
gagccagaactgtctaatg

SEQ ID NO: 161274 - DNA, 19 bp, synthetic construct
  misc_feature 1..19: note = Chemically synthesized
  source 1..19: mol_type = other DNA
tgcccccattagacagttc

SEQ ID NO: 161275 - DNA, 19 bp, synthetic construct
  misc_feature 1..19: note = Chemically synthesized
  source 1..19: mol_type = other DNA
tcgcatgtacattctgcaa

SEQ ID NO: 161276 - DNA, 19 bp, synthetic construct
  misc_feature 1..19: note = Chemically synthesized
  source 1..19: mol_type = other DNA
gaatgtacatgcgactgaa

SEQ ID NO: 161277 - DNA, 19 bp, synthetic construct
  misc_feature 1..19: note = Chemically synthesized
  source 1..19: mol_type = other DNA
aatgtacatgcgactgaaa

SEQ ID NO: 161278 - DNA, 19 bp, synthetic construct
  misc_feature 1..19: note = Chemically synthesized
  source 1..19: mol_type = other DNA
acatgcgactgaaagggtg

SEQ ID NO: 161279 - DNA, 19 bp, synthetic construct
  misc_feature 1..19: note = Chemically synthesized
  source 1..19: mol_type = other DNA
tggtatgggaggtatacta

SEQ ID NO: 161280 - DNA, 19 bp, synthetic construct
  misc_feature 1..19: note = Chemically synthesized
  source 1..19: mol_type = other DNA
atgagccacatggtatggg

SEQ ID NO: 161281 - DNA, 19 bp, synthetic construct
  misc_feature 1..19: note = Chemically synthesized
  source 1..19: mol_type = other DNA
aggatgagccacatggtat

SEQ ID NO: 161282 - DNA, 19 bp, synthetic construct
  misc_feature 1..19: note = Chemically synthesized
  source 1..19: mol_type = other DNA
atggaagtcaacttgctgt

SEQ ID NO: 161283 - DNA, 19 bp, synthetic construct
  misc_feature 1..19: note = Chemically synthesized
  source 1..19: mol_type = other DNA
cttccattctaacccacat

SEQ ID NO: 161284 - DNA, 19 bp, synthetic construct
  misc_feature 1..19: note = Chemically synthesized
  source 1..19: mol_type = other DNA
ctgagttctaaaatcatcg

SEQ ID NO: 161285 - DNA, 19 bp, synthetic construct
  misc_feature 1..19: note = Chemically synthesized
  source 1..19: mol_type = other DNA
ctaaaatcatcggggattt

SEQ ID NO: 161286 - DNA, 19 bp, synthetic construct
  misc_feature 1..19: note = Chemically synthesized
  source 1..19: mol_type = other DNA
taaaatcatcggggatttt

SEQ ID NO: 161287 - DNA, 19 bp, synthetic construct
  misc_feature 1..19: note = Chemically synthesized
  source 1..19: mol_type = other DNA
gctacttgcccattcacca

SEQ ID NO: 161288 - DNA, 19 bp, synthetic construct
  misc_feature 1..19: note = Chemically synthesized
  source 1..19: mol_type = other DNA
cgaactgttgattagaggt

SEQ ID NO: 161289 - DNA, 19 bp, synthetic construct
  misc_feature 1..19: note = Chemically synthesized
  source 1..19: mol_type = other DNA
gaaacaatgaggacctgac

SEQ ID NO: 161290 - DNA, 19 bp, synthetic construct
  misc_feature 1..19: note = Chemically synthesized
  source 1..19: mol_type = other DNA
atagcatctactcttgttc

SEQ ID NO: 161291 - DNA, 19 bp, synthetic construct
  misc_feature 1..19: note = Chemically synthesized
  source 1..19: mol_type = other DNA
ccacttttagaccttatcc

SEQ ID NO: 161292 - DNA, 19 bp, synthetic construct
  misc_feature 1..19: note = Chemically synthesized
  source 1..19: mol_type = other DNA
ttttagaccttatcctggc

SEQ ID NO: 161293 - DNA, 19 bp, synthetic construct
  misc_feature 1..19: note = Chemically synthesized
  source 1..19: mol_type = other DNA
ttaagtggctaccggtttg

SEQ ID NO: 161294 - DNA, 19 bp, synthetic construct
  misc_feature 1..19: note = Chemically synthesized
  source 1..19: mol_type = other DNA
tctgtactagcatattccc

SEQ ID NO: 161295 - DNA, 19 bp, synthetic construct
  misc_feature 1..19: note = Chemically synthesized
  source 1..19: mol_type = other DNA
taaatttaacgaagttcct

SEQ ID NO: 161296 - DNA, 19 bp, synthetic construct
  misc_feature 1..19: note = Chemically synthesized
  source 1..19: mol_type = other DNA
ttaaatttaacgaagttcc

SEQ ID NO: 161297 - DNA, 19 bp, synthetic construct
  misc_feature 1..19: note = Chemically synthesized
  source 1..19: mol_type = other DNA
gtgttttaggctaatatag

SEQ ID NO: 161298 - DNA, 19 bp, synthetic construct
  misc_feature 1..19: note = Chemically synthesized
  source 1..19: mol_type = other DNA
actgctgaaagagatgcgg

SEQ ID NO: 161299 - DNA, 19 bp, synthetic construct
  misc_feature 1..19: note = Chemically synthesized
  source 1..19: mol_type = other DNA
tgctgaaagagatgcggtg

SEQ ID NO: 161300 - DNA, 19 bp, synthetic construct
  misc_feature 1..19: note = Chemically synthesized
  source 1..19: mol_type = other DNA
ccaatctcagggcaagtta

SEQ ID NO: 161301 - DNA, 19 bp, synthetic construct
  misc_feature 1..19: note = Chemically synthesized
  source 1..19: mol_type = other DNA
tctgccctgccttttatgc

SEQ ID NO: 161302 - DNA, 19 bp, synthetic construct
  misc_feature 1..19: note = Chemically synthesized
  source 1..19: mol_type = other DNA
actgctgtcaatgccctgt

SEQ ID NO: 161303 - DNA, 19 bp, synthetic construct
  misc_feature 1..19: note = Chemically synthesized
  source 1..19: mol_type = other DNA
ctgtggggcaaagtgaacg

SEQ ID NO: 161304 - DNA, 19 bp, synthetic construct
  misc_feature 1..19: note = Chemically synthesized
  source 1..19: mol_type = other DNA
cacgttcactttgccccac

SEQ ID NO: 161305 - DNA, 19 bp, synthetic construct
  misc_feature 1..19: note = Chemically synthesized
  source 1..19: mol_type = other DNA
aagtgaacgtggatgcagt

SEQ ID NO: 161306 - DNA, 19 bp, synthetic construct
  misc_feature 1..19: note = Chemically synthesized
  source 1..19: mol_type = other DNA
tttcctaccctcagattac

SEQ ID NO: 161307 - DNA, 19 bp, synthetic construct
  misc_feature 1..19: note = Chemically synthesized
  source 1..19: mol_type = other DNA
ccaccagtaatctgagggt

SEQ ID NO: 161308 - DNA, 19 bp, synthetic construct
  misc_feature 1..19: note = Chemically synthesized
  source 1..19: mol_type = other DNA
attactggtggtctaccct

SEQ ID NO: 161309 - DNA, 19 bp, synthetic construct
  misc_feature 1..19: note = Chemically synthesized
  source 1..19: mol_type = other DNA
ccactcaagagatatggtg

SEQ ID NO: 161310 - DNA, 19 bp, synthetic construct
  misc_feature 1..19: note = Chemically synthesized
  source 1..19: mol_type = other DNA
gtgtgctggcccgcaactt

SEQ ID NO: 161311 - DNA, 19 bp, synthetic construct
  misc_feature 1..19: note = Chemically synthesized
  source 1..19: mol_type = other DNA
gtatacctcccataccatg

SEQ ID NO: 161312 - DNA, 19 bp, synthetic construct
  misc_feature 1..19: note = Chemically synthesized
  source 1..19: mol_type = other DNA
tagaccaccagtaatctga

SEQ ID NO: 161313 - DNA, 30 bp, synthetic construct
  misc_feature 1..30: note = Chemically synthesized
  source 1..30: mol_type = other DNA
ccttgccttgacaaggcaaacttgaccaat

SEQ ID NO: 161314 - DNA, 43 bp, synthetic construct
  misc_feature 1..43: note = Chemically synthesized
  source 1..43: mol_type = other DNA
ccttgccttgaccaatagccttgacaaggcaaacttgaccaat

SEQ ID NO: 161315 - DNA, 78 bp, synthetic construct
  misc_feature 1..78: note = Chemically synthesized
  source 1..78: mol_type = other DNA
gggggccccttccccacactatctcaatgcaaatatctgtctgaaacggtccctggctaaactccacccatgggttgg
